United States Patent Application Publication US 2011/0179523 A1 - sequence listing, part 2

SEQ ID NO: 2747 - protein, 510 aa, Artificial sequence
  consensus sequence
  Variant (2)..(5): Xaa in position 2 to 5 is any amino acid
  Variant (7)..(31): Xaa in position 7 to 31 is any amino acid
  Variant (32)..(54): Xaa in position 32 to 54 is any or no amino acid
  Variant (56)..(103): Xaa in position 56 to 103 is any amino acid
  Variant (104)..(175): Xaa in position 104 to 175 is any or no amino acid
  Variant (177)..(177): Xaa in position 177 is any amino acid
  Variant (180)..(180): Xaa in position 180 is any amino acid
  Variant (184)..(185): Xaa in position 184 to 185 is any amino acid
  Variant (189)..(189): Xaa in position 189 is any amino acid
  Variant (197)..(198): Xaa in position 197 to 198 is any amino acid
  Variant (200)..(201): Xaa in position 200 to 201 is any amino acid
  Variant (203)..(203): Xaa in position 203 is any amino acid
  Variant (204)..(204): Xaa in position 204 is any or no amino acid
  Variant (206)..(206): Xaa in position 206 is any amino acid
  Variant (209)..(209): Xaa in position 209 is any amino acid
  Variant (212)..(213): Xaa in position 212 to 213 is any amino acid
  Variant (216)..(216): Xaa in position 216 is any amino acid
  Variant (224)..(224): Xaa in position 224 is any amino acid
  Variant (226)..(226): Xaa in position 226 is any amino acid
  Variant (229)..(230): Xaa in position 229 to 230 is any amino acid
  Variant (235)..(237): Xaa in position 235 to 237 is any amino acid
  Variant (245)..(245): Xaa in position 245 is any amino acid
  Variant (248)..(248): Xaa in position 248 is any amino acid
  Variant (250)..(250): Xaa in position 250 is any amino acid
  Variant (253)..(255): Xaa in position 253 to 255 is any amino acid
  Variant (257)..(258): Xaa in position 257 to 258 is any amino acid
  Variant (266)..(266): Xaa in position 266 is any amino acid
  Variant (272)..(272): Xaa in position 272 is any amino acid
  Variant (279)..(279): Xaa in position 279 is any amino acid
  Variant (282)..(284): Xaa in position 282 to 284 is any amino acid
  Variant (289)..(289): Xaa in position 289 is any amino acid
  Variant (291)..(291): Xaa in position 291 is any amino acid
  Variant (293)..(293): Xaa in position 293 is any amino acid
  Variant (295)..(295): Xaa in position 295 is any amino acid
  Variant (299)..(301): Xaa in position 299 to 301 is any amino acid
  Variant (306)..(306): Xaa in position 306 is any amino acid
  Variant (309)..(314): Xaa in position 309 to 314 is any amino acid
  Variant (316)..(316): Xaa in position 316 is any amino acid
  Variant (319)..(320): Xaa in position 319 to 320 is any amino acid
  Variant (323)..(324): Xaa in position 323 to 324 is any amino acid
  Variant (326)..(331): Xaa in position 326 to 331 is any amino acid
  Variant (334)..(335): Xaa in position 334 to 335 is any amino acid
  Variant (339)..(339): Xaa in position 339 is any amino acid
  Variant (341)..(341): Xaa in position 341 is any amino acid
  Variant (343)..(345): Xaa in position 343 to 345 is any amino acid
  Variant (349)..(350): Xaa in position 349 to 350 is any amino acid
  Variant (351)..(355): Xaa in position 351 to 355 is any or no amino acid
  Variant (358)..(361): Xaa in position 358 to 361 is any amino acid
  Variant (364)..(364): Xaa in position 364 is any amino acid
  Variant (368)..(368): Xaa in position 368 is any amino acid
  Variant (371)..(374): Xaa in position 371 to 374 is any amino acid
  Variant (377)..(380): Xaa in position 377 to 380 is any amino acid
  Variant (386)..(389): Xaa in position 386 to 389 is any amino acid
  Variant (390)..(391): Xaa in position 390 to 391 is any or no amino acid
  Variant (393)..(396): Xaa in position 393 to 396 is any amino acid
  Variant (398)..(398): Xaa in position 398 is any amino acid
  Variant (400)..(400): Xaa in position 400 is any amino acid
  Variant (402)..(403): Xaa in position 402 to 403 is any amino acid
  Variant (405)..(410): Xaa in position 405 to 410 is any amino acid
  Variant (411)..(411): Xaa in position 411 is any or no amino acid
  Variant (413)..(413): Xaa in position 413 is any amino acid
  Variant (415)..(418): Xaa in position 415 to 418 is any amino acid
  Variant (420)..(422): Xaa in position 420 to 422 is any amino acid
  Variant (424)..(426): Xaa in position 424 to 426 is any amino acid
  Variant (428)..(428): Xaa in position 428 is any amino acid
  Variant (432)..(434): Xaa in position 432 to 434 is any amino acid
  Variant (438)..(440): Xaa in position 438 to 440 is any amino acid
  Variant (442)..(443): Xaa in position 442 to 443 is any amino acid
  Variant (446)..(451): Xaa in position 446 to 451 is any amino acid
  Variant (456)..(458): Xaa in position 456 to 458 is any amino acid
  Variant (460)..(460): Xaa in position 460 is any amino acid
  Variant (463)..(467): Xaa in position 463 to 467 is any amino acid
  Variant (469)..(470): Xaa in position 469 to 470 is any amino acid
  Variant (472)..(472): Xaa in position 472 is any amino acid
  Variant (475)..(475): Xaa in position 475 is any amino acid
  Variant (477)..(477): Xaa in position 477 is any amino acid
  Variant (485)..(486): Xaa in position 485 to 486 is any amino acid
  Variant (488)..(488): Xaa in position 488 is any amino acid
  Variant (490)..(490): Xaa in position 490 is any amino acid
  Variant (491)..(491): Xaa in position 491 is any or no amino acid
  Variant (494)..(494): Xaa in position 494 is any amino acid
  Variant (496)..(496): Xaa in position 496 is any amino acid
  Variant (499)..(502): Xaa in position 499 to 502 is any amino acid
  Variant (503)..(503): Xaa in position 503 is any or no amino acid
  Variant (505)..(509): Xaa in position 505 to 509 is any amino acid
RXXXXFXXXXXXXXXXXXXXXXXXXXXXXXXXXXXXXXXXXXXXXXXXXXXXXXYXXXXXXXXXXXXXXXXXXXXXXXXXXXXXXXXXXXXXXXXXXXXXXXXXXXXXXXXXXXXXXXXXXXXXXXXXXXXXXXXXXXXXXXXXXXXXXXXXXXXXXXXXXXXXXXXXXXXXXXXPXWHXPWKXXRVIXGHLGWVRXXAXXPXXNXWFXTGXXDRXIKIWDLAXGXLKXXLTGHXXXVRGLAVSXRHXYXFSXXXDXXVKCWDLEXNKVIRXYHGHLSXVYXXXLHPTXDXLXTXGRDXXXRVWDXRTXXXXXXLXGHXXTVXXVXXXXXXPQXXTGSXDXTXXXWDLXXXXXXXGKXXXXLTXHKKXVRXXXXHPXXXXFASASXXXXXXKXXXXPXGXFXXNXXXXXXXIXNXXXXNXXXVXXXGXDNGXXXFWDXXXGXXFQXXXXXXQPGSXXXEXGIXXXXXDXXGXRLXTXEADKTIKXXKXDXXATXEXHPXXXXXPXXXXXR

SEQ ID NO: 2748 - protein, 28 aa, Artificial sequence
  protein pattern
  Variant (3)..(3): Xaa in position 3 is any amino acid
  Variant (7)..(8): Xaa in position 7 to 8 is any amino acid
  Variant (9)..(9): Xaa in position 9 is Lys or Arg
  Variant (11)..(11): Xaa in position 11 is Ile or Leu
  Variant (12)..(12): Xaa in position 12 is Ala, Asn, Gln or Ser
  Variant (15)..(15): Xaa in position 15 is any amino acid
  Variant (20)..(20): Xaa in position 20 is Ala, Cys or Ser
  Variant (21)..(21): Xaa in position 21 is any amino acid
  Variant (22)..(22): Xaa in position 22 is Ala, Cys, Ser or Thr
  Variant (23)..(23): Xaa in position 23 is Phe, Ile or Val
  Variant (24)..(24): Xaa in position 24 is Asp or Glu
  Variant (26)..(26): Xaa in position 26 is any amino acid
  Variant (27)..(27): Xaa in position 27 is any or no amino acid
WHXPWKXXXVXXGHXGWVRXXXXXPXXN
